United States Patent Application Publication US 2008/0008996 A1 - sequence listing, part 13

SEQ ID NO: 82314 - DNA, 423 bp, Zea mays
  unsure (1)..(423): unsure at all n locations
agctctatagcangcttccactcancaatatcctttctcctgcacattcgggaaccaagaacttttgctggcaaagggcattgtccaagccttttagcaatctcctctgcagggtcttgcaacttcatgcgtaacagttgggctttgatttctgctccacagaaagcatggtgtctaaaaagagccaaaaactcagtatcatccatgttttccaaatgaatgacatgttcttgttcacaacaaatagcggccggaagtgttcacttcgagaagtaccaaaactttgctccctgactggttagagactaatggagcaaggaataactcccactctgtctcattatgagaattttcaaacccaacatcatccaagacaagcaggaatttctgtgactcttgtagtatatcacgtaatttgcactg

SEQ ID NO: 82315 - DNA, 462 bp, Zea mays
  unsure (1)..(462): unsure at all n locations
agctttatcaaatggacgtgaagagtgcctttctcaatggaccaatcaaggaggaggtctatgttgagcaacctcccggctttgaagacaatgagtaccctaaccatgtttataaactctctaaggtgctttatgggctcaagcaagccccaagagcatggtatgaatgcctaagagattttcttatcactaatggcttcaaagtcggaaaagccgatcctactctctttactaaaacacttgaaaatgatttgtttgtatgccaaatttatgttgatgatatcatatttgggtctactaacgaatctacatgtgatgagtttagtaggatcatgactcacaaattcgagatgtctatgatgggggagttgaagtatttcttaggatttcaagtgaagcaactccaagagggcaccttcattagccaaacatagtacattcaagacatactcacanagtttg

SEQ ID NO: 82316 - DNA, 472 bp, Zea mays
  unsure (1)..(472): unsure at all n locations
acctgaggcatgcaagcttatgacattactgagntgttnctatagtatcatacatgcatgncagannngaattattacttttgactaggctaacttcttcacttgagtaaccggaatctgctntacctgtttgtcttctttgtgattatctcattttaaaagccatttgggtccaatcagaaattggcagggaattccaacacagatttgtaagtattcaaacatgnttgctcgctctttctctttccttcctgcttgataattcctgaattctgttaggccttcatttaatagaattgtcttttgaattactgctctcaggacaagtccagttgagtttgttgtcccctgtggttgctatatggattcactaatatgacattaccatatagggatgagattcaaatgaggtttgagggtgaagaggctctaaagcanagggaagcaattttctggtgcaatagtaattatt

SEQ ID NO: 82317 - DNA, 418 bp, Zea mays
  unsure (1)..(418): unsure at all n locations
agcttatgtacagactgtgcagnataatctggtctgttggtgtgttggatctcactttntatcgatgtcttaatccagaatctggaatataaagcatactaatacaatatccgtgcgttgcgacagcacacaatcatatttgatactcataaagaataaatttcatatcaaagtaaaacatatgatccacatatcaaatattaaactgataagaaaatattacactttatcttaacgaagaggtagagaaatgtatgagttgaaaggagcctgaccctcttttttaacctcgctctacgtgagaatgttatgttgcgtgtaacggtccattggtaggcgagaagcagagtggagaaactgacatactcgcttcgacatgacgcacaacgtaaaaactagtgctttnattaatagagat

SEQ ID NO: 82318 - DNA, 432 bp, Zea mays
  unsure (1)..(432): unsure at all n locations
agcttgttttgtacatattatgaacataatctatagtgcttaatggtaaagcacatcagattctgctactaaaaggagaaagcaccttgcatccacggcacctgcatcctcagcagatataaagaatggtgcattcacaaagacctcactgcacagtgttgactcggttaaaaaagaataatcatgaaaatatcttataagcaactttctaatataaaatatacagagatattctgcatgttcgagaaaaaataaggaatattttgtaattgtaggaggggtggggtggggacaatggagatggtggttgggggatgctagtgggagatagagatccaggaagtggcaaaagaaaaantattgatgaagccctattgcatccatcaggggacattggttatcaatatgctatagatgcggaacanaatatat

SEQ ID NO: 82319 - DNA, 361 bp, Zea mays
cccacatgtgcttaacggcgatgccacagccagcccatgctagtcttatcgattaagcatgcatctagaccggccttctcttttgcaaaatcaactaaatagagtttgccgtctaatacacccttaaaagctaatgaaccatcactccttctaaagacagacacatctacatttgtgaataagcagttatatcccatattacaaagctgactcacaaacaacaagttatatccaagcgactcaactaaaacacattggaaatggagtgctcggatgaaatagctatttttcctaaccctttcaccttgccttgattcccgtcaccgaatatgattgagtcctgggaatctttgttcttgac

SEQ ID NO: 82320 - DNA, 451 bp, Zea mays
  unsure (1)..(451): unsure at all n locations
gcttattgagggctatgaanatgatcctgagaacatgtactaggattttgacatcatgcaaaacatgcaagaatgtggtcaaccccccagtgatcttgtccaagatattgtacctgatctggatctaagcaagttgggacaactgtgagtttttcatgtctttcatgtaaactatctgccattaattntatacacatgtccatgccaaaagaagtctaatcaataagcttgtgggggttattctctgttcaagacagcctaggatgtgttttcttgataaattctgttttatttgtccaacaatgttctaaatgcattttggcttggtcctgctagaatactattcccagactttcctctagagcctagatatgcttctatgcgattatggtttttgtaagagaataaagtgcttgttgtattgcatagggcgtggtatatatgtatatat

SEQ ID NO: 82321 - DNA, 445 bp, Zea mays
  unsure (1)..(445): unsure at all n locations
acatctncaagtccttctgataggtggttctatctcctttctcttacgagtcacctcagtttccccttggcatggcaaaattaagttgcatctttgcttgccacctctatgtagggctagctagatatcgagccagctcaactcgactcgtccgagttcgagctggctcggctcgttaacctaatgatccacagagtcagctcggctcggttcgtttacgacctcgagctgtcccgtttagctcgtgagccagagcagaaaaaataatatgtatataataatcaatttctagttaatttttaaactatattagcagtagaaagtagtaattataccaatagtttcatagaccacatcaatgtaacaccaaattaacacaactcatcactcatcaattcacaattcacacaccatgttaatcagttaacccgctnttatattcaca

SEQ ID NO: 82322 - DNA, 461 bp, Zea mays
  unsure (1)..(461): unsure at all n locations
agcttatcaattaatcataacaattggatcatgtgatatttgatactgaatcgaagcttaaagccgaagtccagaccatctcagaattgaagaaagcattaacaagccttcaagacaaatgcttgaactttggcaataattgtattggacgattaaagaagatatnttactctgttggagccagcagtgggaaatttaacccttcggcggaaaatttaccccaggccttcgatcatattgaagctgaaatcgaagagcttgacgaagttatagccgggcacggcgacttctgtgcctgggtagcttctcggagtaccgctgctgcatttctgaaggccggctgcgaacatggaaaggttgtcaacaggcccaacttcaccttatcttcatcaatcctggatgatatgcccgacctcgcccgaagtatctncaatagaattataaaaatggtatggacaaag

SEQ ID NO: 82323 - DNA, 361 bp, Zea mays
  unsure (1)..(361): unsure at all n locations
ctgctccctgcagcttcagcgagccattcaaaatacagttcgccatactttctgccgctactggataggctggaacttgctgatctgaccactctgatacgaaatcgaccagtgcttgagttttgatgggaacgcaaggtcngaactcgatatcatgggatcccaactcgcaagcccacttggctattcggccaatggcttacttgatgtgaagaatatcccctattggacaaccagtgactactatgactttgtgatcgacaaagtagcggcgcagcttgcgggcagatagaagtactgcatataatagcttctgaactagggatactntntctccacggacctagaacctcactgatga

SEQ ID NO: 82324 - DNA, 468 bp, Zea mays
ctgaggcatgaagcttgaagatcaaaataaagcaagtcccaatatatttttgtttcaaagtggtgagcttggcaaagaataattacacagaggtggagaaagggttgtatggtgtggtaatggccttcaagaagcttcgggattatttccaggcttaccatataattgttccctcgtcacagcctctgaaggatattatgaggaacagagaagctactggaaaggttggaaagtgggttgtggagctcaatgaattcaccattgactacgtgcatagatcttcaattcaatctcaggcgctagcagacttcatagctgactagacgccaggggctcacgaagaagggacaagcaaagatgccgaagcttggacagtattctgtgatggttcttggggaaccttcggtgcaagagcagctgcggttctagtcgcaccttcaaatgtataacatgtttcgcagcaaactg

SEQ ID NO: 82325 - DNA, 440 bp, Zea mays
  unsure (1)..(440): unsure at all n locations
agcttgaggaccgggtggttcgggcatagggcttcgtttctncccgctgtcgaagcgtcccccacgcctggggtggaatcctcagcgcaccctctcgtcgaggtgggctctacggtcgcggcgatggtgctcattgtcgaggcggcccggtgacgcatgcgctgtgtcccacgtgcgcccgatgtggaccgaggcctcccgcatgaatcggaaagtcgcgacgtgatgcttcggagggtatccctgccttcgggaggcagagctttcggaccatcggaccgcggcatcctacaggagattcctgagttctccctggatactccgcccctcggtggtggatggttctggcatcgttcggagcagtattgctgctgcagccaagtactggcttaccacactggaagccggtggcagccttgccctatcatcgtcggagatgc

SEQ ID NO: 82326 - DNA, 364 bp, Zea mays
cgggagcaaatagcaagagagcgtgccaaatgcgcttgcagtatgatcttaattatacgcccagggcgttgaaaaatgaaagaccccgcatgccagtgaatgttgctattctaacaaagggaagggtgtttttcggaccttcggcttaaagccttcgctcatgtcgcaatctaaatttattattttaaacaaatttatattgcgaggggctactggttggggccttcggcttacgaaggtcctcaaaaacatgatttaacagtatttctggagtataatgtgtgaacaggtatcttcggactcgagtctgcatcacagtatgagaagcccacaacaatacgaaggttgatacagcgccgaagat

SEQ ID NO: 82327 - DNA, 354 bp, Zea mays
accggcggactttatgtgtggccgagaacgacctcaacggacttcgggcctccgccgccgcgcgtggaccaagccatacagggagaccccgcccaaatccttgcgctcatatcttctctggcataccatggacccccctgacccatttgattgaactatcttcgccgtgaccaggccggtctcctcgacggcgacaaagcatctcgcctgcgcgcgtggaccgaccgactccgggcatctccgacggtgatccgcacacacgtgggatccccgagaccatcccttcgtactcgaccacttcaccggagcaatctcgccgccggtaagcccctcgcctttcttcaccgcggtact

SEQ ID NO: 82328 - DNA, 413 bp, Zea mays
gttcattttgagaaagacaggatgtgtagcgcatgccaagccgggaagcaagttggcacccaccatccacacaagaacatcatgactagtgacaggccactagagctcctacacatggatttattcggcccgattgcttacataagcatcagcgggagtaagaactgtctagttattgtggatgactattctcgcttcactcgggtgttctttttgcaggacaaatctcatacccaagaaaccttaaagggattcttgagacgagctcaaaatgagtgcgggttaaggatcacgataattagaagcgacaatgtgacggagttcaagaactctcacattgaaggcgttcttgaagaggagggcatcaagcatgagttctcttctcctacacttcacaacaaaatggtgtagtg

SEQ ID NO: 82329 - DNA, 448 bp, Zea mays
atgcaagctggtacaacatgagagtcatgagcgactccttggttgcagaatatttgctacgtgtcggtgatggaaatgaggaagtgaacatcgatggtgatgttcgtcttccagatgaggtatgtgtgccatataccggcgatgaccgcgtccttgacagattgatagatgacatttaccccagtctaaacgaaaacatgtctaatacaagctacatcacttcaagagcaatattgactactcggaacgactgggtggatataataaatatgaggatgatcgatcgtttccaacgggagcagatgatgtaccatagctttgacaccgcggtggacgatcccaataactattatccatcggaattcctaaacacgctgactcctaatggactaccccacacgttctgaagttcaaaattgggtgcccaatcatgttgcttaggaatata

SEQ ID NO: 82330 - DNA, 370 bp, Zea mays
agtctcggctggcaaactgcttgccggtgtcgactgttaattccgacggtactccgaagcggcaaacaatgttttgccaaaagaatttttgtgcagtctttgatgttattgaggaaacggccctcacttctatccatttggtaaagtattcgacagcgacgaaggcgaacttaaggttcccctgagccgtacgcaagggcccgacgatgtccaggccccaacgctggagaggccatgtgtgggcgatcagttttgtgaattgcgaggggctgcctgatcgaggacaaatattctggcaggcttcgcaggaccttgcaacctgatttgcagcgcatatcattgcaggccaatagaagccttggcggatcac

SEQ ID NO: 82331 - DNA, 414 bp, Zea mays
ccattggattaacctacctggacggaaagggttccaacatttggcgctgcccggaccgaaaggttccaacacaccccctcactttatagcaataggttttctatttaatgtgtcgcgatctgtaaaggtgaaagggttaatatctgggtatgtaatttttttggatttaggagtaaatttggatgagacctgaagcccaacattttgtattaccaaaaattttaattagatgtacgctagacgaaatggtcctaagttcaggtgcaacactaagtttcaatcgagctagagcaaagttatgaaatctatagtgccaagtttattatacataccaaatattttaattctttatcttattttttaggattcagggtattaatgacaacattattactaaaaacagaagctgcatat

SEQ ID NO: 82332 - DNA, 444 bp, Zea mays
  unsure (1)..(444): unsure at all n locations
agcttgtgaaggttcttcatccccacatgtgctatgttgctgatgccacagccagcccatgctagtcttagctattaagcatgcatctagaccggcctcttcttttgcaaaatcaactaaataaaagttgccggctaatacacccttagaagctaatgaaccatcgcttcttctaaagacagacacatctatatgtgaaatagacaattatatcccatatgacataattgactcacagatagcagattgtatccaagactctctactaaaaatacattagagatagaatgctcattagaaatcngcaatttacctaaaccttttaccttgccttgattcccatcaccgaatacaattgaatcttgggaatctttattctcgacgtaggaggagaacatcttcttctccccgtcatatggttgtgcatccgctgcgataatcagc

SEQ ID NO: 82333 - DNA, 441 bp, Zea mays
acgcagcagcaactgacttggaaaacaactcgttgtatccccgatagacagatcataactcaggaaaaaaataaattaaagaaactactcgagtacatcggagtctcaatgtgaatacttcatggtgctgcttcactaggatcacaaacatcttggtctcaccttttcaaggcaacacaaatcgaacatgtgacttgaaccatatcaccatatatgagctcaactcatggcttcaactcaccttactgatgcatcaacacaatataactcttcatagctgattagttcatcggcttagtgcaagcactctattcttcaccttagccatggaacctcggtccataagccatcgcttggccttcaccttcgcttagtccctcgaagccctatccttgctatcttcacctaataagccattcttgagtcacatcattttgagca

SEQ ID NO: 82334 - DNA, 445 bp, Zea mays
  unsure (1)..(445): unsure at all n locations
gcttgtgaaggttcttcatccctacatgtgctatgctgtgatgccacagccagcccatgctagtcttagctattaagcatgcatctagaccggcctcttcttttgcaaaatcaactaaataaagtgtgccgtctaatacacccttaaaagctagtgaaccatcacttcttctaaagacagacacatctacattcgtaaatagacagttatatcccatattgcataattgacttacagatagtaaattatatcccagagactcaactaaaaacacattagaaattgagtgctcatttgagatngcaattttacctaacccttttacattgccttgattcccatcaccgaatataattgaatcttgggaatccttatcttgacgtaggaggtgaacatcttcttctnccccgtcatatgggttgtgcatccgctgtcgataatccag

SEQ ID NO: 82335 - DNA, 358 bp, Zea mays
  unsure (1)..(358): unsure at all n locations
cccatgtgagtcttaacaatacagcacgtgtccagctccccgtctatcacaagctaccaaggatagctgaccctataacactcccttaaatgctatagaatcatcactccttctaaagacagtgacacctatatcagtgaatagacacgtggagcccatttgacataattgagaaacagaaagcacgctgcaatctaaagaatcaacaagaaaaacattggaaatagaatgcgcaggagatatagcaattttacccaatccttngaccaaaccttgaattccatccccggaagtgatcgctctttggggaccttggctcttctcatatgaggagaacatcatcttctcccctgcatga

SEQ ID NO: 82336 - DNA, 392 bp, Zea mays
agcttggaggcgtcgattggtaggcttcttgttgtggactcctccttcttctcttccggcgcctagtatgcaacaggcagtgcttccgatgtagacggatcatcaagctcgttgatcttgctcgagccttcgatcatgcactcaaaacttacataatgcccgattacttcctcgggggtcattttagtatatctaggattaccacgaattaattgaacttgagtagggttaaggaaaataagagatcttaaaataaccttaaccacttcatggtcataccactttacgctcccgagggtgcgcacttggttcaccaaagtcttgagccggttgcacatgtgttgaggctcctcacctttgcaagccggaaccgaccgagctacccctcgatc

SEQ ID NO: 82337 - DNA, 434 bp, Zea mays
  unsure (1)..(434): unsure at all n locations
agcttgcattgatgtnaaattactttatttgctctatggctgggccaacctaattgagataaccgccaacaaagcgagtgaaaaagcttaacttggatcaaacttgacaagtcttatgtttataagcttttagcacttaaattcctacttattatgcaattgttgggtcttgaaatatgcatgaagtactgcacttagggggagtattcaaaactcaaatcactcatgaagacccctagtgcaaggccaaaatgcaaatttcaccatttgcctattttctctaaaaattaactagcctatggaaaaatattttgaaaaatatgagaaaaatatatgagggtgccaatacctgtcccaacaagtgttattttgtgtgattataagatgggatttggtttggtgggaactagatagaaaatcaaaaatccaaattt

SEQ ID NO: 82338 - DNA, 449 bp, Zea mays
  unsure (1)..(449): unsure at all n locations
agcttacccatgatgaggcatgtgactagttatagggtcctcgatcatcaagcctacatcgacaaggtccttaatcgactcaaacagagacactacatcgagactctcttctcgtgcaagtcacccgcccggtctcagttttatcatttcaaaccccaaagtttggtacctagcagaggtacatattttctgatgttgaacccatcatggccatgatggatccaccatcaagttttattttcgaaaacatcccacccacttgaaacatcatcttttgtcaaaacaaaacattctggttttctagagcaaagctaagcataagaaaaacctttttgtaaaacagagatttaaggagaagtaatcaaatccaaggaaggaaatgcagcaactgggttaacacacaactcctatcacttaattcatcangtaagtgagaaagatntaaaata

SEQ ID NO: 82339 - DNA, 448 bp, Zea mays
  unsure (1)..(448): unsure at all n locations
gagcttgatctctaccggnaaatcagatcttcttaattaataatttatcatgaattttatagccatatgcatgaaataatatgtctgcgatgtcctttgcttcaggggcagctctattaccgatgatgggttggcagctttagcaaatggatgcaagaggatcaagttactgaacttgtgttactgcaacaagatcactgatagtggtttgggtcacttaagctccctggaggagctcacaaaccttgaactgaggtgcttggtccgcataacaggcattgggatctcctcagttgcaatcggatgcaagaacctgatagagctggacttgaaacgatgctattcggttgatgacgctggcctgtgggctcttgctcgttatgctntgaaccttagacaggtaaccttatggtagagtttaccttctacccttgcaaagtcataagct

SEQ ID NO: 82340 - DNA, 419 bp, Zea mays
ggacattctcagcttccacaaaacaaacaaacaatctataaatctccgttggaccctgagaaatgatcttctatatttccgaagtaataattctagattgtaagctgctttggcttttctaggcatcatagcatatggttgtataagatatcctcgtcctagaataccatgatgataatctatatactccctcttgtcctcttagactctccaaccgggtctctagaacctcgtctgccttaaattttagagaagattcttgttctctacgcttacagtaacatcctctaaacgaccctataaatatagaggatgctcgtagatcctctatatatagagagtgtctctctcttctcatctattcactctaatactgtaaataatagaattagcacaactaacatacgtataatacatct

SEQ ID NO: 82341 - DNA, 445 bp, Zea mays
  unsure (1)..(445): unsure at all n locations
agcttgtgcaaagtccactcgaactaatcttctgagaaacccgacctcgctgcaacatgacacccgaaggtccaacacaacaagcaatgaatgaattcagaattattgcagagcatatcagtacaagggacctggttcaggagtttttggctttcaaagnttttcccaatttgaaagaatggaaaatgccgaagctaaagggggagaagaaagaaggtgaacttgtacgtttaccttaccatttcaagtttaagaaatactttaaagcgccttgccaagagtggctagacacaattgaagtaatgtgtaatgaaatacttggcaattattccaaaaaagaagatcaattaatgactacagccttcggcacccgtccgaagcgaagactgaaccgagtgttggacgccttgggttttgaataccctgactatganaatctgaacaa

SEQ ID NO: 82342 - DNA, 477 bp, Zea mays
  unsure (1)..(477): unsure at all n locations
tgcggcatgcaagcttgacacggtcacaggacgagcaccacctttttcttttattttcgaacggcgccaacctccgcgcgaagctcgggcgagctgttgacgatgcccaagtctgacgcgcgagccccaggtgtcatcgggaaaggagaaggcgcgcccgcgactgacccggagggcccacatgtcggcaccacctgctattctgggccgcgcagcgcattttggttactgggccgaaacgaataattctgggcccaggcgctgcagtttctgttttccttttcagattttcattttcctttcatttcccattcaaattagctccaaattcaaatgttgtgtgacaaattctatcctcagattatgttatgtcatgacaagctctagcttgcgcatatatacttatacatacctattatanttttatttcacatgatattcggttgtttctctttcctanatatttgaatccctttt

SEQ ID NO: 82343 - DNA, 426 bp, Zea mays
agctgtaatcacagatatgctgacacattctgtctagaacgcactaggatctgagggccggacagcaatatcctatcctgcaaccaccttgctgtccagaattcggtgctggccccatcaccaactacagggagcactagctaattaaagaaggaacgggccttcttcgggattatcattgggagaccaatccagggcctacaggggtttgttctagacagccatagccatctcattcgaacggcccagcagagttcttttaaactggagatacccagcccaccaagctgaagggggcggaaaccttactcacgccaccaggcagtgaccccattaccttttttgacctcccagaggaaacttaccttaacttgcaatggcatcaaaccccattgagggcatacactgacattgcatataaaccgc

SEQ ID NO: 82344 - DNA, 443 bp, Zea mays
cagcatcaagcttctaacgcgagacacgtgatacgttttatctccgcctaacttgcacacgatacaccttgtgcaacctcgtcagcacgttaacaaatgggaggagcacatcacagcaagaatgtgatgaccacctcaaaacctctggagctgctgcatatggacctcttcggacccggcagctatctgagtataggaagaagtaagtatggattaactgttgctgatgacttttcccgctccactcgagtgttctattgcatgataagtctgaaacccaagggaccctcaagcgcttcctcaagagagatcaaaatgagtttgagctccacgagaagaaataaagagcgacaatgggtcctagttcaagaaccttcaaatggaggaattccttgaggaggaaagaatcaagcacgaattctccgctctctacacaccacagc

SEQ ID NO: 82345 - DNA, 462 bp, Zea mays
  unsure (1)..(462): unsure at all n locations
cagcatgcaaacttaatangcaaataatttttactgtcattcgtgaaaatgaccgccgacggatggctcatgaaataatatacaaaagcgatataaatactcatgatgctccagaagcaacgaaagcagctgaaaaagctgcggagctcgaaagacgaatagtattacttaatggcttctaactttgtcgcatatgtttgtgactccgaactaatttattgtttctaccgcagctgaactatctcctcccccaaagccattcgactcgctggccgacccagagataaagaaaacaatagatattattaatatggccgaagctattgtggatgaagttgctaccaagctgctaaccgaagctgctgaaaaagctctgaacgaagaagagtagctattgtcaaaacattntttaagatattaatgcaatatctactgagctaaatctgaatactcgatgttgga

SEQ ID NO: 82346 - DNA, 414 bp, Zea mays
  unsure (1)..(414): unsure at all n locations
ttaatttgattattacggctcatgggtgatgtttgacatgtgttggacattgttcgattccccaacccaaaactctagttttctaagtaataattgctttattccagtataaaactgactcggaaaaccctagattccctggtgcaccgagaaggaaagttgtatttaagatacaacttgatgtatctctatgatgattgcatattcatagcatcacatgagcattcatgtatatgtatggttatgtatagaaaacgaagaagtatatgtcgaagaagaagagactgcaccaccaactgagactccacctgttgggaattgtttttctttagatatctgtggaacagatcctgactcccctacaacacaaggcaagccccggngcacttaccttgttccttgtgaatttaactc

SEQ ID NO: 82347 - DNA, 439 bp, Zea mays
  unsure (1)..(439): unsure at all n locations
catgcaaacttgcaatacttgtttaaacaacaacatttatccagacagcanctcgcagaccataccggtaacttggcccttagcatgcttggggctagatatgatcggacctttcaagaaagctcaaggaggatacactcacgtgttggtagcaatcgacaaattcactaaaaggatagagttcaaacccattgcttctttaacctcagctaaagccgcggaattcatacaagacatcatattcaggtttggaataccgaacagcatcataaccgacttggggtccaacttcacaagttcagaattcttcgatttctatgagcaaaaaagcattcaggtcaagtatgcttcggtagcacacccgagagccaacgggcaggttgaacgagctaacgggatgatatnggaggcactcacataaaaggtctttgataagaat

SEQ ID NO: 82348 - DNA, 375 bp, Zea mays
  unsure (1)..(375): unsure at all n locations
aggaaatgggagcgagagcaatgaggagtctgctctctttgtgacaaaattcaaccaattcctgaggaagaagaaaggtcaacctacaaaaagccccacatccagaagaaatgattttaatgatagaaagtgttttgagtgtgtggaacccggtcacattgtcatgaattgctcaaacaagaagaataagggcaaagatggagatgataaaaagaagatattctatcacaaggagaaggatatcaaagcctatctagttgaatgggattcaaatgctacctcggatgatgatgatgatgattcctcatccaaactaaatgctagaatcactatcaaggaggctccttcactcttctcatctcctcatngnctcat

SEQ ID NO: 82349 - DNA, 386 bp, Zea mays
acagaacatacccgtaacatggtcatttgcgtgctggggactggacatgattagacccttcaagagagcttatggaggatacactcaccgtgtggtcgccattgcacaattcaccaaatggatagaatagcaactcattgcttctctaacttgagctaaggcagagggattcatactagatataatattcacgcttgggataccaaatagcatcataaccgacctaggatccaatttcgctagctctgaattctttgaattatgcgaacaacggggcatccaaatcaaatatgcattagtagcacacccaagagccaacggtcaggtagaaagggctaatggaatgatactggaagcactcatgaagatagtctttgacaagaatg

SEQ ID NO: 82350 - DNA, 382 bp, Zea mays
  unsure (1)..(382): unsure at all n locations
ctggctcaccggagcagcgggatcaccatcgncggacattggccgcccggcactgatcgtataccgggccaccaggtgaagcattcttcgatttctggcacccacgacctgcctgacctctcgtgaaagctcccgacttactagtttgtgctatgtcgtcgtggttagggccggaatctcgncgccaacgaagcttcccacctgcgcacgaggcccgaccaacttcggccatccccaacaatgatccgcacaccgacgtgaccgtcgngacctccactacatcatcgaccacttcgctggagctatatcaacgccagagagtctcgctaccgtgatctctgccgcgggtactattccaagacaccaggaaccgcggattaga

SEQ ID NO: 82351 - DNA, 299 bp, Zea mays
catgcagcttgtcatatgacttacacatgacacaatggttgtgttatatcctagaaaaaatgttgccaaaggttgatcttcggtgcatggatgtgggaaaagggttgtgggccgttggatgctaagtcagagtcatctgtggcgtcgcttcttttctcccgcaagaaaaccatagtggtggccttttccccttttgccctaacttggcggcacccctttccgcactcccacactagggcgaccctcccttctttgcccttgcgctggctgttctctccttccatggcagtccctcttca

SEQ ID NO: 82352 - DNA, 457 bp, Zea mays
  unsure (1)..(457): unsure at all n locations
agcttctgtgccaaaattcacagaaagctaagggatggttatttagttgtgactttccaaagtttagtgtcaaaaaggcactttccactaccttgttatttgaaaaatgtcaaacaacagaatttatatttttcatatgttcttcataacaaaagattaactatcctaagggttggagtgttctcaccttgcggttatttctgtagggtttttctaagttttccttgttttcttaaaataaaaggcatcctatttattttatactaaaccagggtataatcaattcttctagtacactacactgaataagtatactaataaaaatatgggggctccctggttctttatttaaatcacctttcttattttctttaaccttangcataatgtaaaataaatggcaaactctaccttaatggngtgtacagaggggtttagcaattttaaataggtcagt

SEQ ID NO: 82353 - DNA, 419 bp, Zea mays
  unsure (1)..(419): unsure at all n locations
agcttatgaatgaaaaattattaatgctcgtatgttggcttgttctaactcacgagttgtactttatactggtaagattaagattgaaaaataagctcaagtctcgtaagccgataaatatattagataattaactcgctatttagtctttaataataaatatatgttggtgtttcgaacctccgacaaataaatntattgtgcgtgtgttaggctctggatggtgtatacggtggacgcaaaatttatactgatttggacggaatgtccctacttccagttttagtcatcaacgactttcgctactgacatcattgatgattaaaactcgtagtagggttacaagcgggtgaaagagagaagagagactttcaagtcttttattcgtggtggaggcggttacaaagatggagtctaac

SEQ ID NO: 82354 - DNA, 443 bp, Zea mays
  unsure (1)..(443): unsure at all n locations
agcttggcctttagccttggtcggggatggtgtccccttctttccatcggtgtgcccaagcccaacaacaccttcaccagaaggctgggtgtcggatttagcggctagggttttggacctctttggcgacggcggattctccttcgccgcatccaattgagcgagcgcggctggacccttggacttagccgacgaggtagacccatcaggcagcaatttgggggacttcgctggggacgacgcccgcttggacctcgccggcgaaggcggtttctccgccaccgctgcagcctccggttcgacctctgcgccgtcggtcttcgcctgcggcttcttcggagacggcgctgctttcttcgccttgctggcggcggcccgtgcgttccccatcagcacgtncgccaccgtgcgcttcccagcggagccgccaccggaggccgaca

SEQ ID NO: 82355 - DNA, 449 bp, Zea mays
agcttgtaccttcaccactctgcaactggttctttatatattggagctgtgatcctgtgggtgcgggcatacgtcttggcctctcaggctaaatcctgtaggtcttgttgcatgaatcaaaggatggcagataccacacgatgggtcctatgggtgtgcccctaacacttcagaaccgaagctgtgtgcaggtccaggtcccagcccagtaataggtactctcaaactatagagactaccccctaggggccggaccaccaactttttctttggtgtactggtatccagcctcgacatgtcgagcctacatcccagggggccaagtaccagggagaagttggtaacgctacacacaggtttatcaacgacaaataacatacagataagtactaatacagcttgattaatggttctcaaaagtatgtgacactaccaaaagttattacaag

SEQ ID NO: 82356 - DNA, 431 bp, Zea mays
  unsure (1)..(431): unsure at all n locations
cctaactattaagattgatggcctattatactgggtcgttatctaatacaggggcctaaaggctaagggcttgagggttagcttgatccaaaatagatcgattcatcgggttaggacaaacatcccgactgatggattaacaacaacatcgcttcattggcagccacatctttctcttcattaggtaatatattcaaatctaaaggagctagctctaccggtcgttccaaaccatacaaattaaacggtaattcatgcccttagggtccttaggaggaattgggtcctcatcaaccggngtctcccctaataagttntgtattaagacttcacattgcaccgaccaggagcaaccttgaaatagatccgaaatcgagaagacaattaactaaaggacatcctatatagcggccagtctatctttgataatg

SEQ ID NO: 82357 - DNA, 442 bp, Zea mays
agcttctaaagggagaacatgcgataggtttgtctaacgtgcatttcgaaaaagatagaccgtgtgcagcttgtcaagcaggtaaacaagtgggaggagcgcattacagcaagaatgtgatgaccacttcaagacccctggagttgctgcatatggatctcttcggacccggcgtctatctgagcataggagggagtaagtatggtctagttattgttgatgactttttccgcttcacttgggtgttctttttgcaggataagtctgaaacccaagggaccctcaagcgcttcctcacgagagctcaaaatgagtttgagctcaaagtgaacaagataatgagcgacaacgggttcgagttcaagaaccttcaagtggaggagtttcttgaggaggaagggatcaagcatgagttcttcgctccctacacaccacagcaaaa

SEQ ID NO: 82358 - DNA, 439 bp, Zea mays
agcttgaagccatggtaagtagcatatgccaataatatgcgaattgactcaagcctagctacgggtgcataggtttcaccgaaatccaaaccttcgacttgtgaatatcctttggccacgagtcgagctttgtttcttgtcaccacaccatgctcgtcttgtttgttgcggaagacccatttggttcctacaacattttggttaggacgtggaactaaatgccatacctcattcctagagaagttgttgagctcctcttgcattgccaccacccaatccgaatcttggagtgcttcctctaccctgtgtggctcaatagaggaaacaaacgagtaatgttcacaaaaatgtgcaacccgagatcgagtagttacccccttatgaatatcgccgaggatggtgtcgacggcgtgatctcgtcggatcgctcggtggactc

SEQ ID NO: 82359 - DNA, 484 bp, Zea mays
  unsure (1)..(484): unsure at all n locations
ctcgacccggatcttaagtcacctgcggcatgcaagcttcggtataggcgatgttagtttctccggaagatcttncttttcttgctccgctgcctcagttcctaaaggtctaacttcagcgcaggccagagaagcacttgcagcaatggctcctcccaactccccaattttgtcttcagaagtcttagtagaagcaggagttggcaccttcaaagatttcagaacagcatccagaacgctggccattctccttccttttctataagttgctgctggagcagatgctaattntgacaaccccatcatgcttgggggactctccagctttggatactcctctgtctttgaactctntgcctctgttttttctaatggagcgacagtagcttcgacggtcacaacaggaattatctccgaagccaagggggtggnttcgacatattcaataatttctatcttctttgtgacaggagcagcagcagta
